United States Patent Application Publication US 2004/0110668 A1 - sequence listing, part 2

SEQ ID NO: 4449 - DNA, 531 bp, Homo sapiens
  misc_feature 175, 185, 205, 213, 225, 235, 237, 250, 255, 259, 267, 276,286, 287, 289, 292, 293, 303, 306, 312, 313, 319, 322, 324,325, 335, 337, 340, 343, 368, 379, 386, 398, 401, 403, 416,417, 421, 422, 427, 432, 447, 455, 458, 471, 480, 488: n = A,T,C or G
  misc_feature 489, 493, 494, 502, 503, 504, 506, 521: n = A,T,C or G
acgcgggtgcacactttgggaagcatcaccatgaaggtgagggacagagctctggagctttcaccgccttgagtgtccttcttccagtgatcttagaccttgggaggaaagaaaaagccattctcaatgaaaatctgagggagccctttccaaggcattggagattgagaagttnacgacttcantaggagaaaaggaactgcanaatgtggntgaaaatagaangcaaacttgnanttaaaacttgggnactgnaggnccggcccnaataggctnaaacctgggnntnccnnaacttttggngangcctgnngggggnctnannaccaatgtcntnganatngagaccctccttggctacacagagnaaccctgtctntacttanaaatacaatatnaananaaataatccattnntaanntacgnggggnggcttttgaggcaanccatccgntangggctttttgttnaaggggcanggctggannttgnngaaaaccnnnanataagtttttttttntttgaaagga

SEQ ID NO: 4450 - DNA, 624 bp, Homo sapiens
  misc_feature 5, 7, 12, 21, 27, 40, 47, 48, 49, 53, 74, 76, 77, 100, 104,121, 124, 140, 151, 153, 155, 156, 160, 162, 173, 175, 178,181, 193, 202, 206, 210, 229, 231, 235, 236, 241, 247, 248,255, 256, 257, 267, 270, 275, 301, 320, 323, 329, 330: n = A,T,C or G
  misc_feature 338, 343, 349, 358, 359, 371, 373, 379, 386, 388, 398, 404,408, 414, 417, 440, 454, 489, 496, 511, 518, 531, 547, 554,568, 595, 598, 613, 615, 623: n = A,T,C or G
gcgtngnccccngccgttttnctggcngagctgaggctcnaattccnnnaggncaacgtggtgggactcaccgntnnggccagggtgcttatggaaacangtgncgaggacgccgaatgtntgnaccaaccaaaacctgncgccgacggcntngnnaagngnacacaacccananacnatnccccatctgttntgccctggntgcntcanccctaccatcactgggcangnctanngggcntcgtanngaggaannncctgaacttnctntgganagtgaagataaaggatgaaggctacnagaagaccaaggaagctgnttngctccnnaagaaacntaaancctggnatgatatcnnaaaggcctatgncnctcagngagtgananctggcgccangcaaantganaaaccntcngcgtatccagcgcaggggcccgngcatcatctataangaggataatggtatcatcaaggcctcagaaacatnctggaantactctgcttaatgnaagcccnctggacattttgnaacgtgcccctggtgngctagtnggaccttttttaanttttacctgaaacgcctttccggaaanttnatgaattgttccttncnggccggcng

SEQ ID NO: 4451 - DNA, 721 bp, Homo sapiens
  misc_feature 81, 91, 95, 99, 111, 133, 137, 144, 155, 161, 185, 202, 204,207, 235, 255, 272, 286, 293, 299, 307, 311, 321, 339, 354,356, 357, 365, 369, 372, 378, 380, 403, 407, 418, 426, 427,432, 435, 437, 453, 459, 472, 498, 500, 512, 515: n = A,T,C or G
  misc_feature 523, 527, 529, 539, 553, 556, 562, 587, 590, 591, 601, 618,626, 627, 629, 632, 636, 639, 656, 658, 666, 671, 672, 673,680, 692, 694, 705: n = A,T,C or G
actttttttttttttttttttttttttttttattagggcaagtgcatgttctgtaacatatttcacttgcaagcatgaaanatgaggtctntctntttntacatgggccgntcccggggtctggtcacaatanaccnccacagngggggcaaatnaccttnctttcgggcagggggcaaagcttnagttaaaggaccaccangnggngtttcctcctgcagctgcttaacctttngttcccagttttccctccgnagttttttccactgttntctcttggcaaagnaatcagngatacnttgccttntcanaaggatgccngttatttaagcaccattntggggaccttggtancnntcagtgtntttnatnggaagngnccccagaaaagtcaagggaaganttantggttgtggangctacggnncatanatnantttaaacaagatcaancctcgntttcatgaacagnacactattacagtaaccaagtttttntncccattaagtgnggntctccacncttncntttgtaaggncattaagatatccncanattcantgttttattttacccctcaaaaatncannaaagaattgncttgaaaaaatggaaanactaaacnngngantgcntgnatcctctgtaatttagngngcaaaaancctgnnntttttgngggaaaaattantntatttgttggncggagattttttttta

SEQ ID NO: 4452 - DNA, 592 bp, Homo sapiens
  misc_feature 39, 49, 76, 84, 88, 108, 111, 137, 138, 179, 185, 189, 206,211, 217, 218, 226, 233, 240, 249, 256, 259, 269, 279, 298,321, 322, 326, 339, 365, 386, 392, 399, 403, 414, 415, 416,417, 418, 421, 426, 430, 433, 439, 440, 444, 448, 450: n = A,T,C or G
  misc_feature 455, 462, 474, 477, 484, 495, 504, 505, 506, 514, 523, 533,535, 539, 546, 547, 548, 550, 552, 553, 563, 567, 572, 573,576, 578, 580, 581, 585, 589: n = A,T,C or G
ggtacaatgcctatcgcttcttaatccaaaacgttctgnggctccaganggaggaagaaatagaatttctctacantgaaaacncggntagagaaagccccaacattncanaccgggggatcctgtccttcatgcanntctttcattggctcttttgagactgaaatggcagcttatangctttntacngtggtgcctcgcctggncaagncttgtnnatattctnaccaaanggtatgntaataatgnaccgcanaanatttaagggngaaatatggnatggatgattgttgatatngccctataaaccttgtaaagtgnnttgntttttctttgcanacttatggatccctacccaccttttntcctgaattgaatgtaccttnccctgnacggccnctanagggctaattnnnnncancttgntggncgnttcttnntgantccnancatcngtacccnagctttggcgtnttncatgggncaatagctttnttccctgannnaaattgtnattcctctntcaattttananaaantttccgnnntntnnagccatatancggnaaacnntcngngnncgcnatanaat

SEQ ID NO: 4453 - DNA, 577 bp, Homo sapiens
  misc_feature 3, 49, 65, 88, 94, 118, 172, 205, 208, 216, 232, 246, 255,287, 289, 293, 308, 309, 314, 336, 345, 351, 352, 353, 359,367, 385, 392, 395, 398, 400, 404, 412, 421, 429, 438, 446,449, 454, 455, 459, 460, 462, 467, 476, 480, 482, 486: n = A,T,C or G
  misc_feature 499, 508, 515, 529, 539, 541, 546, 549, 567, 568, 569, 573,576: n = A,T,C or G
acngcggggctcactgagcaccgtcccagcatccggacaccacagcggnccttcgttccacgcanaaaaccacacttctcaaaccttnactcancacttccttccccaaagcctgaanatgcacaaggaggaacatgagggggctgtgctgggggcaccccccagcaccatncttccaaggtccaccgtgatcaacatccacagnganacctccgngcccgaccatgtcgtntggtcccttgtttnaacaccctnttcttgaactggtgcttgtctgggcttaatancntttngcctactccgggaanntctanggacaggaagatggttggcganttgaccggngcccannnctatcnttatccgncaatgtgccttgaacatntgggccntgnttntnggcnttccatantgaccattngattaatnctgtgactnggtatttntgntcttnnacanntnttccnttattttgntttntnatantacagggaaaaancggggttantattagncacccattctcggnaatcttttgnanttatnttnttaaagctggtcctagannntggngcnt

SEQ ID NO: 4454 - DNA, 621 bp, Homo sapiens
  misc_feature 13, 20, 23, 73, 79, 93, 95, 96, 105, 121, 148, 151, 152,156, 169, 172, 179, 180, 181, 190, 193, 197, 203, 205, 210,212, 222, 224, 236, 248, 266, 280, 281, 287, 293, 306, 311,316, 320, 321, 333, 335, 341, 351, 353, 358, 371, 378: n = A,T,C or G
  misc_feature 379, 381, 382, 388, 392, 403, 405, 409, 414, 420, 426, 430,433, 436, 439, 440, 445, 448, 449, 451, 460, 478, 480, 484,495, 496, 500, 504, 509, 516, 518, 520, 527, 540, 546, 555,558, 562, 564, 565, 566, 576, 590, 591, 598, 599, 602: n = A,T,C or G
  misc_feature 603, 607, 611, 616: n = A,T,C or G
gcgtggccgcggncgatgtncancacaggctacatgtaggcaagctaaagctatcatgaaaggaggatacagnatggcnaagatcctggtctntnngtatcattnactatcctccatgcanggggaagcagcatgtcttcttggcccntgnnctgnacatactggagcnaangtctatnnngatgatacnctntcangcaacntnccatntnttctaacagntngaattcacattncaatatatgatncatcctatagggaaattncttttggaaaggcnnatgaanatctanttatttaattcanaatgngactngctnncaatcaatcttntntttcgnatacctactncnaattntctctacttttgngatgccnnannaacacncttngttggaatctnantctntactngatctnttcttnttgnacnaantannccctngcnnangaaatcttnttggaaatattacctgtnantcanttggccttaannttgntggncttanttttacnangnttcatcncaaagctttggantacaantgggaaaanctnattnannnttcccaatantctttctttgatgnnaaatatnnaanncttnttgngcgcntcctt

SEQ ID NO: 4455 - DNA, 597 bp, Homo sapiens
  misc_feature 3, 5, 34, 37, 62, 87, 113, 124, 125, 133, 139, 152, 163,176, 179, 191, 208, 209, 212, 246, 249, 265, 278, 280, 282,295, 298, 314, 319, 322, 342, 347, 348, 357, 362, 363, 365,372, 374, 380, 386, 387, 388, 389, 393, 397, 398, 401: n = A,T,C or G
  misc_feature 403, 413, 416, 423, 425, 430, 432, 451, 454, 461, 462, 463,468, 472, 488, 493, 494, 498, 499, 502, 506, 507, 512, 517,522, 529, 537, 540, 544, 546, 554, 556, 561, 562, 573, 578,579, 584, 585, 593: n = A,T,C or G
atntnccatgaaatatccatgaacatacttatangtnaagtattatttatttgaatctacanaaaacaacaaataatttttaaatanaatgatcttcctagatattgcacggnagaatatacannatagctanattgangccaagggccaanagaatatccgnacttaaatttcanganttgaatgggttngctagaatgtgattttnnaancatcacatataatatgatgggacaataaattttnccntattagtcaaatttancttggaaaatccngnancttttttctgttnaanatcggctaccctaagntgctnttncatgatccacaaagtccttnttccnngcgccctcnggttnncntctttantntctaangtggtnnnnaggntttnnccncncatcttaccntcncagtgantntttgngngggacattgggtgaagcanatnttaagtnnnttgcntcanaacaataaattatttntcaanngggnnacntatnnacccntctgnatatnttcgggntagaatgnaancaancntatatttngngcctnnatttcgcatantcttnnttaanntacttttntatt

SEQ ID NO: 4456 - DNA, 657 bp, Homo sapiens
  misc_feature 254, 256, 258, 259, 262, 268, 272, 276, 279, 281, 282, 284,286, 287, 291, 294, 300, 302, 303, 304, 308, 310, 312, 314,322, 324, 327, 328, 331, 332, 335, 338, 345, 351, 352, 354,355, 356, 360, 362, 370, 375, 377, 379, 383, 384, 385: n = A,T,C or G
  misc_feature 391, 401, 403, 408, 412, 415, 419, 425, 427, 431, 432, 433,434, 435, 439, 443, 446, 454, 455, 461, 462, 463, 480, 491,492, 503, 507, 548, 564, 567, 571, 575, 580, 582, 587, 590,626, 627, 637, 639, 653: n = A,T,C or G
acgcgggggagggcggtggctcaggctcctggaaaggaccgtccacccctccgcgctggcggtgtggacgcggaactcagcggagaaacgcgattgagaaatggaaaagaaaatgaaataaatcagcagttatgaggcagagcctaagagaactatggcaacatcaggtgactgtcccagaagtgaatcgcagggagaagagcctgctgagtgcagtgaggcgggtctcctgcaggagggagtacctcggcccnancnnccntaaggncaanttcnacncnntngnnggcngtncttatngnnnccancntngnacccaacntnggnntannaanggnattactngtttcnngnnnaaantnttattccnttacnantncccnnnacattncaacccgaancnttaangggnaancccngggtgncntatnnnnngacntacntanatttattnncttggnnntacttgcccgttttcantcggaaaactnntttggcccttncttnattaaatcgcccaccccccgggaaagcgtttgctttttggngcttttcccttcctcnttnattnattncttgncntggcnttnggttggggaaccggtttaacttatttaaaggcggannacggtttccnanattagggttacccngaaa

SEQ ID NO: 4457 - DNA, 616 bp, Homo sapiens
  misc_feature 24, 52, 58, 79, 83, 88, 117, 127, 131, 146, 151, 176, 192,201, 212, 224, 234, 240, 258, 275, 278, 285, 307, 310, 321,323, 333, 337, 338, 358, 360, 363, 367, 374, 375, 378, 404,421, 428, 433, 441, 452, 454, 463, 467, 477, 482, 489: n = A,T,C or G
  misc_feature 490, 522, 535, 536, 539, 541, 552, 559, 566, 567, 569, 575,580, 582, 583, 585, 586, 592, 595, 601, 606, 610, 616: n = A,T,C or G
ggtacttttttttttttttttttntttttttttctttttttttttttttttnaattgnccaaatttttattttaatgcncagnatganaaatgaacttttttaaatcaactgatttntatggaaaangacncggcaaataaattanacctntgttaaagcgaaggtcagctaaatntccaaacttaaggatntaatgggcnccgataaacanattccacagtcntttttaatanagtatntttcaaacacaactttgntaaaaactggtccaaanatngacagcncgtgggaatgcttaacaggggnggngatcagggacncntttcctgggngccnnttatgatgatgttgtccacncncanaatnacctttnntgntttatctgcactcaaaaaaacctgtngcttcatttagaaaacntttctgngtatncccagggnttgcccttttntnccatggggncctncccttatttncattnccactannggggtttgccctttacttgtgagcaagccctngtgcttggccccnngtncngccctgctatntcctgcnatatgtnnancttttntgggngnncnnttcttnggnttttcnataanactncttgcn

SEQ ID NO: 4458 - DNA, 600 bp, Homo sapiens
  misc_feature 4, 9, 10, 17, 19, 20, 24, 32, 35, 36, 37, 40, 41, 46, 47,48, 49, 55, 59, 62, 67, 72, 74, 75, 81, 82, 83, 90, 95,96, 98, 101, 103, 111, 116, 158, 163, 172, 188, 217, 225,226, 227, 235, 239, 277, 279, 281, 286, 287, 288, 295, 298: n = A,T,C or G
  misc_feature 300, 310, 327, 357, 365, 389, 408, 422, 440, 444, 448, 478,481, 483, 485, 490, 493, 512, 530, 532, 538, 540, 564, 570,576, 579, 580: n = A,T,C or G
gcgngggcnnggccgangnncacnggctgctnccnnngtnntattnnnngtatcngaancangagtnacatntnncaaacnnngacttangagcnncntcngnggactctnggctntcaacatgcacatggcggactctggattgatgctggaagttnatacngaaaatganaacaacaatggaacanaaacactttctggagcatatggcttctangggcgccnnnaacagatnccangtggatctggaacttgagattgaaaatatgggtgctcntntnaatgnnnatacctncananagcagactgnatactatgccaaaacantctctaaagacttgccatgagctgtagaanttcttgcngatatactacaaaacagccattgngagaagcaaatattgaacntgagccgtggagtnatccttatagagatgcangaangttnaatcctatttacaagaaaatgtttttgatnatntntntgccncancttatcaaaaaactgcgcntggacaggacaattttgngncccacngntaaaattcaaattttttagtcttnacggantttatnggnntattttacccccccttttcg

SEQ ID NO: 4459 - DNA, 632 bp, Homo sapiens
  misc_feature 79, 99, 119, 147, 154, 220, 224, 228, 230, 365, 377, 389,394, 396, 401, 412, 413, 415, 416, 425, 438, 480, 487, 489,493, 494, 496, 500, 503, 509, 510, 518, 523, 524, 533, 537,539, 547, 549, 550, 553, 558, 559, 565, 566, 574, 576: n = A,T,C or G
  misc_feature 577, 578, 585, 587, 591, 592, 599, 600, 603, 604, 609, 610,612, 617, 619, 620, 621, 624, 625, 627, 628, 629, 631: n = A,T,C or G
ggtacttttttttttttttttttttttttttagggccaggtttattccctcacatgggtggttcacatacacagcacanaggcacgggcaccatggganagggcagcactcctgccttntgaggggatcttggcctcacggtgtaanaaggganaggatggtttctcttctgccctcactagggcctagggaacccaggagcaaatcccaccacgccttncatntctnanccaaggagaagccaccttggtgacgtttagttccaaccattatagtaagtggagaagggattggcctggtcccaaccattacaggggtgaaaatataaacagtaaaggaaaaatcccgtttggatgaaggccccnggaaaggagcanatgaccccttcnaaacntnttccngggaaaggcanntnnctgggcctnttgggctgttaancccttgctttggcagaaaggttagggaaaatgatggggctcntttgttngnattnntnatgnccncaaatnnggctttgnggaanncccccccanggancntccctttngnntgntggcnnttcttnnggttcccnannnaaaactncntaannaacgggnnttnnccccnntnaaaantnnnttnncnnntnt

SEQ ID NO: 4460 - DNA, 659 bp, Homo sapiens
  misc_feature 5, 9, 80, 88, 208, 228, 242, 252, 274, 330, 332, 333, 344,345, 388, 405, 434, 445, 450, 451, 452, 455, 459, 462, 476,489, 490, 493, 494, 496, 501, 506, 510, 523, 525, 526, 532,542, 543, 545, 553, 554, 556, 559, 560, 564, 570, 576: n = A,T,C or G
  misc_feature 577, 582, 600, 603, 606, 607, 608, 609, 610, 613, 615, 619,623, 625, 628, 631, 638, 644, 649, 653, 654, 655: n = A,T,C or G
ggtantttngggagctacagatagtaaagatgatgatgacattgacctctttggatctgatgatgaggaggaaagtgaanaagcaaanaggctaagggaagaacgtcttgcacaatatgaatcaaagaaagccaaaaaacctgcacttgttgccaagtcttccatcttactagatgtgaaacctcgggatgatgagacagatatggcnaaattagaggagtgcgtcanaagcattcaagcanacggcttagnctggggctcatctaaactaagntccagtgggatacggaattaagaaacttcaaatacagtgtgtagtcgaagatgatnannttggaacaganntgctggaggagccaggatcactgcttttgaggactatgtcgancccatggatgtggctgntttctacatgatctaaaatccatctggancatggcatttnaaatnnnaanattntcnggattttgtctcgngctgggctgtatnncanngncctantttcngatntctttgctggctncnnttgggngtatctcatnntngtatccannanagnngttnctcttnccgggnnggccngtttaaatggggaaattnttnaannnnnggncntttnttangnaanccnaccttgnaccaantgggntaannntggg

SEQ ID NO: 4461 - DNA, 666 bp, Homo sapiens
  misc_feature 1, 3, 13, 15, 17, 22, 41, 48, 54, 57, 64, 86, 99, 100, 114,116, 120, 128, 130, 132, 152, 154, 156, 157, 158, 161, 166,167, 175, 177, 185, 191, 223, 241, 247, 251, 253, 256, 257,263, 267, 270, 279, 281, 290, 293, 296, 299, 302, 314: n = A,T,C or G
  misc_feature 316, 320, 322, 364, 375, 380, 387, 397, 404, 415, 419, 435,440, 442, 443, 448, 455, 459, 467, 478, 500, 502, 507, 523,532, 543, 550, 560, 561, 604, 611, 622, 625, 630, 639, 647,650: n = A,T,C or G
ncnagcggccgcncngncgggnacgcggggctcttcctgcnctacatnatggcncangatcaangtgaagaggataaccccatgcnggaacttcacatnngcgaactctgtctnancatntgtgttgngnanagtggacacagactgacgcnancnnncanggtgnnggagcagntnacagggcntacccntgtgttttccaaagctagatcactgtcagatnctttggcatccggaaaantgaaangatngntgnncactgnacanttngaggggccnangcagaaganatnttnganaanggtctaaaggtncnggantntgagttaagaaaaaacaacttctcagatctggaaactttggntttgggatccnggaanacatcgntctggggatnaaatatnacccaagcatnggtntctacagcctgtactnttatntnnggctnggtacgncacntttcagcntctcaaaacangaaactcacgacacgctggatngnggccntacacgaaatcagctnagaagaagncctgcctgttncagccanaagtttgatnnggtcatacttctggcaaataattccgttctatccaaaaaaccntaacatntttggccaacnaanaaacnaaaaaaaantcccgggntcntttgtgcccgaccgcc

SEQ ID NO: 4462 - DNA, 672 bp, Homo sapiens
  misc_feature 97, 155, 160, 171, 177, 180, 181, 195, 208, 214, 220, 229,235, 241, 256, 266, 284, 291, 296, 298, 301, 307, 311, 312,313, 316, 322, 327, 339, 340, 343, 345, 350, 356, 360, 365,374, 378, 379, 386, 393, 394, 398, 405, 410, 413, 416: n = A,T,C or G
  misc_feature 417, 418, 420, 422, 424, 425, 436, 438, 439, 451, 457, 464,466, 470, 472, 480, 481, 490, 497, 501, 503, 504, 505, 507,521, 527, 532, 533, 534, 535, 545, 552, 557, 558, 562, 572,581, 583, 587, 588, 595, 601, 607, 609, 624, 632, 639: n = A,T,C or G
  misc_feature 645, 651, 656, 660, 661, 662, 666, 667, 668, 670, 671: n = A,T,C or G
ggtacttgcatgtaggacaactcagttagaaaagtatagtgaatggatggaatctactgtatgataaaaatgctacaaacaccatttagttgccatnaataagaaatatacttgttttaaaaaaatccaaatgctggcattgtccagaaaaattnaacangtttatttatnattatnatnnagctgaaccgtggnaacttgttctctngaaacnaattancttgcattnatgccntacgtnttctctttcattgcnattatactcncacagatgaaattggttntactttnaattnantgntttctntccnnntcntttccncatgntattgcttctcnnttntnctctntggctntctntctancgttttttntctnntaccttntttctgnncttntttatcnatctnttnatnnntntnanntttattttttntnntatttctttgtnttgccnttttgcntnttancntttaaatnncttctacanctttttntttntnnntnataatttatatctnttattntcggnnnnctttttattngtctttnttttnntttngatttctatntttcatacntntacnntttttanttatgnatctcntntctctatcataatancttccatntatggantccttntccttnctatngttnnnttcnnntnng

SEQ ID NO: 4463 - DNA, 553 bp, Homo sapiens
  misc_feature 4, 8, 41, 101, 121, 136, 140, 158, 166, 167, 168, 169, 173,174, 175, 178, 180, 186, 189, 191, 194, 196, 200, 205, 206,217, 220, 222, 229, 231, 253, 274, 280, 301, 309, 312, 316,320, 331, 348, 353, 357, 361, 380, 381, 402, 408, 411: n = A,T,C or G
  misc_feature 412, 416, 422, 434, 459, 465, 466, 467, 480, 483, 486, 495,503, 513, 518, 519, 522, 532, 553: n = A,T,C or G
acanagtnttttcaacaacctgaattttaagtttctttctncaatgtctgccctctacatggaccttccataatctttctgcaatgtgatcatgctctganatgatggcataaaggaggcnttggggtgggatgangcangctgggctggggcttctntttccagnnnncttnnngangnctgatncancncantntttntaatnntatattctaangcntnctgaatntnaatcaaatgcccacacctccanatcctgaactatgaagacttncttttnggaaagaatatcattattganagtgctgnaanagtngctncctccgtggtntaaatcactatctagcnatatnaccntatngatctcctccaccaccaanntctaaagaacttatgggctcnctcggnaanntatnaatttntctccactccanttaaaagaccttagaatgagggctnaaatgnnnaaaaaaaaaaatntcnccntgacccatnttaggggntcacctgaanctctnnaangataaattgncatttgcttccaaaaaatctn

SEQ ID NO: 4464 - DNA, 644 bp, Homo sapiens
  misc_feature 92, 117, 132, 181, 240, 250, 251, 280, 283, 287, 307, 308,331, 336, 340, 349, 360, 370, 372, 374, 375, 378, 382, 386,389, 391, 392, 396, 405, 416, 422, 423, 425, 442, 444, 447,450, 451, 454, 465, 466, 471, 472, 474, 475, 476, 478: n = A,T,C or G
  misc_feature 479, 483, 485, 486, 490, 491, 505, 511, 519, 520, 524, 525,527, 528, 530, 534, 535, 537, 539, 540, 544, 545, 557, 560,561, 566, 583, 586, 591, 593, 595, 599, 600, 603, 607, 608,611, 612, 613, 615, 616, 622, 632, 633, 634, 635: n = A,T,C or G
accaccctgagttcctgtccaggcctatcaagccctccccaccatactttggcctcctcctggcctctgtggggcggctctcacattacctncagaaaggcttgcaggctctcaccnagggacacctatagntgacaggagtggaagcagctcccctgactctgaaatcaccgaactgaantttccatcaataaaatcatgactgatcttgtagcggatgattcttcaagatacccttcnaacttgggtnnagtttacagctctgactttacacttcggnttngganactttctttaaattatgttnntattaaaattattttattatgcngaaanggtntttgggaanctttgtcactngtatttcccntnannttntacnttcngcngnngaancactctaangcggcgaattncaagtnnantggcctgccgaaactantnggntcnnganctacggtaccnngcttnngnnnannatangnnatanncttgattccatgantgaaanttattatnnattnncnntnacgnnantnnattnnatccgggaaagnatnnaaggngaaaagccctggggagnctnaaatnantnatgnntantcannttnnntnntatttngcttaatctnnnnttatctggt

SEQ ID NO: 4465 - DNA, 275 bp, Homo sapiens
  misc_feature 16, 18, 29, 31, 44, 56, 59, 70, 83, 89, 91, 100, 112, 115,161, 173, 178, 181, 190, 194, 219, 220, 225, 246, 252, 253,254, 255, 263: n = A,T,C or G
gtacgcgggggatttncnatgcggggaanangtggttttgacanaatgcctcctgntcngggtgggcgtnccatgcctccatntataananattatgatnatatgagccctngtngaggaccaccttcccctcctcccggacgaggcggccggggtggtancagaactcggantcttnctnttcctcctncacnaccacctatagggggagacctcatnnccttntgacataacagggagacctgnaaaccnnnncaactgcntggtttggtttc

SEQ ID NO: 4466 - DNA, 597 bp, Homo sapiens
  misc_feature 3, 89, 179, 188, 190, 193, 210, 213, 215, 232, 237, 243,244, 246, 260, 275, 277, 279, 283, 289, 290, 291, 305, 307,310, 334, 335, 338, 356, 370, 371, 379, 387, 394, 398, 411,423, 424, 431, 432, 434, 435, 444, 446, 451, 455, 456: n = A,T,C or G
  misc_feature 469, 478, 480, 502, 504, 532, 533, 537, 544, 545, 556, 557,563, 565, 570, 571, 572, 576, 579, 580, 590, 591: n = A,T,C or G
acnagaaaagggtccgagcacaagccaagaagtttgcgccctcataagcagcgaccttgtggcatcgtcagaaggaagggattggtttnggcaagaacttgtttacaacatttttgcaaatctaaagttgctccatacaatgactagtcacctgggggggttgggcgggcgccatcttncattgccgncnctnggtgtgcggacattganttncntgaattgcccgtatacntacanggtatnntncttccgtccttttnggattttagaatggntntntaanaactcnnntttttattttaatntnagntggccagtattctcaaactgctgnnaanaatataaaactttttaanactttggggtaaanncccccatnggccgaanttccccnctcntgggaatgccagnccatgctttttnnacccganncnnaacttggcncnttggncctnnagctgggctgtantagaaaatngntacctcttcccttctggcctgntncctttttttaaaacctttcatataaacnngcgngtctggnnctgtcttttcnnacctcnanactcnnntggnatnnattttcgggnncttgcg

SEQ ID NO: 4467 - DNA, 634 bp, Homo sapiens
  misc_feature 39, 42, 79, 142, 159, 183, 210, 211, 222, 245, 248, 279,287, 298, 299, 314, 317, 320, 331, 332, 334, 340, 346, 358,364, 375, 376, 379, 389, 402, 405, 409, 434, 436, 438, 441,445, 453, 458, 460, 461, 462, 465, 469, 481, 482, 486: n = A,T,C or G
  misc_feature 488, 490, 493, 496, 506, 512, 514, 519, 525, 546, 548, 549,550, 561, 563, 565, 571, 572, 579, 582, 587, 588, 591, 598,600, 606, 607, 608, 610, 618, 626, 634: n = A,T,C or G
ggtactttttttttttttttttttttttaatcatcacangcncgtgcactttattgaatgacactgtatacaggtgtgngggtataaactgctgtatctaggggcaggaccaagggggcaggggcaacagccccagcgtgcngggccaacattgcacantggagtgcaaaggttgcatgctangggcggctactaataaccccgttttcnngtattatctgnaacataatatggtagacttggcncanagccgaataccactaacaggaggaatccaantggtcatngaggatgcccnnaaatcaagggcccanatnttnaatgccctttnncngctgangcatangcctgggccccnggttanttctcccatcnnttnttcttgtccnctagacttcactngtnttangcgaattgcttttgaaagccccatnanantcntccncttatatntaaanannnggnttgnacaatgggctcnntacntnantgngtntggtcccggnatggtntntcctntggatntttgatcacctctctcaaccntnnnaaagaatggtntntngggggnncctccanganaaacnnctnatttttntncctggnnntntattggcnttgggcanggaaattn

SEQ ID NO: 4468 - DNA, 583 bp, Homo sapiens
  misc_feature 2, 45, 102, 123, 146, 148, 149, 161, 180, 186, 190, 191,202, 205, 210, 214, 220, 224, 227, 257, 271, 275, 277, 301,303, 309, 328, 333, 339, 371, 387, 391, 397, 402, 406, 412,420, 423, 430, 432, 439, 440, 443, 444, 449, 455, 457: n = A,T,C or G
  misc_feature 458, 460, 461, 464, 466, 471, 474, 477, 480, 485, 489, 493,502, 507, 510, 515, 520, 534, 541, 554, 562, 566, 569, 570,576, 578: n = A,T,C or G
anatttggccctggttgatttctcttctgaatagtttccatcccnatgaagaggacctctcaagtattagtgcgacaccacttccagaggagtttgaattanaaggatttttggcattgagancttctttcaggaacttggatttntnnaaaggtcaccanggtattacaggggacaaanaaggtnagcnncgacgaatacnacngcaangctngatctntatnggnaaatggattgttgataatcatcctaggctnattcagtgtgaaantgangnagggaaattgttgggtatcacgananatcccngaattaatactggaagacnccagngtagcnaaagagaaccgattctacaagaacaatctganatagagtcgcttgctntaantgggantccanggtntaaaancagggtgnttntacaaancncgaaaannaannatatntttttntnncnnganangaatncanttnggnctttncaangatntttttgggnaccanggnttggnctttncctaaaatcttggnggccttnaatattaaacttnaaggggantttnggnngtttantntcttt

SEQ ID NO: 4469 - DNA, 622 bp, Homo sapiens
  misc_feature 92, 132, 181, 186, 215, 234, 244, 246, 248, 253, 257, 262,263, 288, 290, 291, 295, 300, 306, 307, 313, 319, 321, 323,331, 332, 333, 338, 344, 348, 350, 358, 363, 371, 372, 375,377, 378, 385, 389, 391, 393, 395, 397, 402, 403, 406: n = A,T,C or G
  misc_feature 411, 417, 424, 427, 440, 450, 456, 462, 469, 472, 499, 501,502, 503, 510, 511, 512, 514, 520, 529, 534, 552, 566, 568,572, 578, 580, 589, 595, 599, 603, 604, 608, 612, 616: n = A,T,C or G
ggtacctgcaggcctcctacacctacctctctctgggcttctatttcgaccgcgatgatgtggctctggaaggcgtgagccacttcttccgngaactggccgaggagaagcgcgagggctacgagcgtctcntgaagatgcaaaaccagcgtggcggccgcgctctcttccaggacatcanagaanccagctgaagatgagtggggtaaaacccnagacgccatgaaagctgcnatggccctgnananaaagntganccagnnccttttggaacttaatgccctgggngnntgtngcgcnctggcnnccattnttgtanantnttctggannntttancttctntatnangtgggaanttganactgtatnnagnannattgttngatnantntnanctaannttntattntgttgngggtgcncangttgctttggctngtctgaaatnttcttntagatnggataancantttcagctatgtatttaagattatctncnnnaattctnnngntgaccnttgggatanggctntcttctttatttaaaatnggttatgtatatcntntatntctttntntcatgaggnttgctntttnaatnntcanacanctcncccttg

SEQ ID NO: 4470 - DNA, 514 bp, Homo sapiens
  misc_feature 28, 41, 55, 58, 76, 78, 100, 103, 118, 123, 128, 133, 144,148, 153, 166, 175, 179, 180, 208, 216, 238, 246, 259, 260,263, 294, 319, 329, 338, 343, 345, 356, 362, 373, 376, 383,391, 392, 393, 400, 424, 433, 440, 445, 453, 467, 472: n = A,T,C or G
  misc_feature 473, 480, 489, 493, 502, 510: n = A,T,C or G
gtacgagatggcacccctccagagcccnttctatggagatnagatgaatcttttntcnctgtgccataagatcaancngtgtgactacccaccactcccnggngagcactactccganaagtnaccanaactngtcagcatgtncatntgccntgacccccaccanatacctganatcnnatacgtgcaccaggtggccaagcagatncacatatngatgtccagcacctgagcatgnatgcaccngtccttatcaaanncangcaccactttgccttacttgagtcgtctctnttcaagtggccacctggtagcctanaacagataanacccagggntcagnangttccccaaangctgcncaaccttacancanatgcttnaggcatannnaactganggaggggcgctggccacaatgtgnactgatggntagattncaaanttcctttntttatactgtgtgnagcanntctaaanttggtcaantaangcaaggggnggtcaacncagc

SEQ ID NO: 4471 - protein, 158 aa, Homo sapiens
MASRSMRLLLLLSCLAKTGVLGDIIMRPSCAPGWFYHKSNCYGYFRKLRNWSDAELECQSYGNGAHLASILSLKEASTIAEYISGYQRSQPIWIGLHDPQKRQQWQWIDGAMYLYRSWSGKSMGGNKHCAEMSSNNNFLTWSSNECNKRQHFLCKYRP

SEQ ID NO: 4472 - DNA, 1200 bp, Homo sapiens
aagatataaaagctccagaaacgttgactgggaccactggagacactgaagaaggcaggggcccttagagtcttggttgccaaacagatttgcagatcaaggagaacccaggagtttcaaagaagcgctagtaaggtctctgagatccttgcactagctacatcctcagggtaggaggaagatggcttccagaagcatgcggctgctcctattgctgagctgcctggccaaaacaggagtcctgggtgatatcatcatgagacccagctgtgctcctggatggttttaccacaagtccaattgctatggttacttcaggaagctgaggaactggtctgatgccgagctcgagtgtcagtcttacggaaacggagcccacctggcatctatcctgagtttaaaggaagccagcaccatagcagagtacataagtggctatcagagaagccagccgatatggattggcctgcacgacccacagaagaggcagcagtggcagtggattgatggggccatgtatctgtacagatcctggtctggcaagtccatgggtgggaacaagcactgtgctgagatgagctccaataacaactttttaacttggagcagcaacgaatgcaacaagcgccaacacttcctgtgcaagtaccgaccatagagcaagaatcaagattctgctaactcctgcacagccccgtcctcttcctttctgctagcctggctaaatctgctcattatttcagaggggaaacctagcaaactaagagtgataagggccctactacactggcttttttaggcttagagacagaaactttagcattggcccagtagtggcttctagctctaaatgtttgccccgccatccctttccacagtatccttcttccctcctcccctgtctctggctgtctcgagcagtctagaagagtgcatctccagcctatgaaacagctgggtctttggccataagaagtaaagatttgaagacagaaggaagaaactcaggagtaagcttctagaccccttcagcttctacacccttctgccctctctccattgcctgcaccccaccccagccactcaactcctgcttgtttttcctttggccataggaaggtttaccagtagaatccttgctaggttgatgtgggccatacattcctttaataaaccattgtgtacataagaaaaaaaaaa

SEQ ID NO: 4473 - protein, 175 aa, Homo sapiens
MEKIPVSAFLLLVALSYTLARDTTVKPGAKKDTKDSRPKLPQTLSRGWGDQLIWTQTYEEALYKSKTSNKPLMIIHHLDECPHSQALKKVFAENKEIQKLAEQFVLLNLVYETTDKHLSPDGQYVPRIMFVDPSLTVRADITGRYSNRLYAYEPADTALLLDNMKKALKLLKTEL

SEQ ID NO: 4474 - DNA, 1077 bp, Homo sapiens
accgcatcctagccgccgactcacacaaggcaggtgggtgaggaaatccagagttgccatggagaaaattccagtgtcagcattcttgctccttgtggccctctcctacactctggccagagataccacagtcaaacctggagccaaaaaggacacaaaggactctcgacccaaactgccccagaccctctccagaggttggggtgaccaactcatctggactcagacatatgaagaagctctatataaatccaagacaagcaacaaacccttgatgattattcatcacttggatgagtgcccacacagtcaagctttaaagaaagtgtttgctgaaaataaagaaatccagaaattggcagagcagtttgtcctcctcaatctggtttatgaaacaactgacaaacacctttctcctgatggccagtatgtccccaggattatgtttgttgacccatctctgacagttagagccgatatcactggaagatattcaaatcgtctctatgcttacgaacctgcagatacagctctgttgcttgacaacatgaagaaagctctcaagttgctgaagactgaattgtaaagaaaaaaaatctccaagcccttctgtctgtcaggccttgagacttgaaaccagaagaagtgtgagaagactggctagtgtggaagcatagtgaacacactgattaggttatggtttaatgttacaacaactattttttaagaaaaacatgttttagaaatttggtttcaagtgtacatgtgtgaaaacaatattgtatactaccatagtgagccatgattttctaaaaaaaaaataaatgttttgggggtgttctgttttctccaacttggtctttcacagtggttcgtttaccaaataggattaaacacacacaaaatgctcaaggaagggacaagacaaaaccaaaactagttcaaatgatgaagaccaaagaccaagttatcatctcaccacaccacaggttctcactagatgactgtaagtagacacgagcttaatcaacagaagtatcaagccatgtgctttagcataaaaaaaaaaaaaaaaaa

SEQ ID NO: 4475 - protein, 303 aa, Homo sapiens
MRAWIFFLLCLAGRALAAPQQEALPDETEVVEETVAEVTEVSVGANPVQVEVGEFDDGAEETEEEVVAENPCQNHHCKHGKVCELDENNTPMCVCQDPTSCPAPIGEFEKVCSNDNKTFDSSCHFFATKCTLEGTKKGHKLHLDYIGPCKYIPPCLDSELTEFPLRMRDWLKNVLVTLYERDEDNNLLTEKQKLRVKKIHENEKRLEAGDHPVELLARDFEKNYNMYIFPVHWQFGQLDQHPIDGYLSHTELAPLRAPLIPMEHCTTRFFETCDLDNDKYIALDEWAGCFGIKQKDIDKDLVI

SEQ ID NO: 4476 - DNA, 2133 bp, Homo sapiens
cgggagagcgcgctctgcctgccgcctgcctgcctgccactgagggttcccagcaccatgagggcctggatcttctttctcctttgcctggccgggagggccttggcagcccctcagcaagaagccctgcctgatgagacagaggtggtggaagaaactgtggcagaggtgactgaggtatctgtgggagctaatcctgtccaggtggaagtaggagaatttgatgatggtgcagaggaaaccgaagaggaggtggtggcggaaaatccctgccagaaccaccactgcaaacacggcaaggtgtgcgagctggatgagaacaacacccccatgtgcgtgtgccaggaccccaccagctgcccagcccccattggcgagtttgagaaggtgtgcagcaatgacaacaagaccttcgactcttcctgccacttctttgccacaaagtgcaccctggagggcaccaagaagggccacaagctccacctggactacatcgggccttgcaaatacatccccccttgcctggactctgagctgaccgaattccccctgcgcatgcgggactggctcaagaacgtcctggtcaccctgtatgagagggatgaggacaacaaccttctgactgagaagcagaagctgcgggtgaagaagatccatgagaatgagaagcgcctggaggcaggagaccaccccgtggagctgctggcccgggacttcgagaagaactataacatgtacatcttccctgtacactggcagttcggccagctggaccagcaccccattgacgggtacctctcccacaccgagctggctccactgcgtgctcccctcatccccatggagcattgcaccacccgctttttcgagacctgtgacctggacaatgacaagtacatcgccctggatgagtgggccggctgcttcggcatcaagcagaaggatatcgacaaggatcttgtgatctaaatccactccttccacagtaccggattctctctttaaccctccccttcgtgtttcccccaatgtttaaaatgtttggatggtttgttgttctgcctggagacaaggtgctaacatagatttaagtgaatacattaacggtgctaaaaatgaaaattctaacccaagacatgacattcttagctgtaacttaactattaaggccttttccacacgcattaatagtcccatttttctcttgccatttgtagctttgcccattgtcttattggcacatgggtggacacggatctgctgggctctgccttaaacacacattgcagcttcaacttttctctttagtgttctgtttgaaactaatacttaccgagtcagactttgtgttcatttcatttcagggtcttggctgcctgtgggcttccccaggtggcctggaggtgggcaaagggaagtaacagacacacgatgttgtcaaggatggttttgggactagaggctcagtggtgggagagatccctgcagaatccaccaaccagaacgtggtttgcctgaggctgtaactgagagaaagattctggggctgtcttatgaaaatatagacattctcacataagcccagttcatcaccatttcctcctttacctttcagtgcagtttcttttcacattaggctgttggttcaaacttttgggagcacggactgtcagttctctgggaagtggtcagcgcatcctgcagggcttctcctcctctgtcttttggagaaccagggctcttctcaggggctctagggactgccaggctgtttcagccaggaaggccaaaatcaagagtgagatgtagaaagttgtaaaatagaaaaagtggagttggtgaatcggttgttctttcctcacatttggatgattgtcataaggtttttagcatgttcctccttttcttcaccctcccctttgttcttctattaatcaagagaaacttcaaagttaatgggatggtcggatctcacaggctgagaactcgttcacctccaagcatttcatgaaaaagctgcttcttattaatcatacaaactctcaccatgatgtgaagagtttcacaaatctttcaaaataaaaagtaatgacttagaaactgaaaaaaaaaaaaaaaaaaaaaaaaaaaaaa

SEQ ID NO: 4477 - protein, 218 aa, Homo sapiens
MEKLVIQLKESFGGSSEIVDQLEVEIRNMTLLVEKLETLDKNNVLAIRREIVALKTKLKECEASKDQNTPVVHPPPTPGSCGHGGVVNISKPSVVQLNWRGFSYLYGAWGRDYSPQHPNKGLYWVAPLNTDGRLLEYYILYNTLDDLLLYINARELRITYGQGSGTAVYNNNMYVNMYNTGNIARVNLTTNTIAVTQTLPNAAYNNRFSYANVAWQAY

SEQ ID NO: 4478 - DNA, 2840 bp, Homo sapiens
cggcctctcatttctcctagcccttctgttcttccttggccaagctgcaggggatttgggggatgtgggacctccaattcccagccccggcttcagctctttcccaggtgttgactccagctccagcttcagctccagctccaggtcgggctccagctccagccgcagcttaggcagcggaggttctgtgtcccagttgttttccaatttcaccggctccgtggatgaccgtgggacctgccagtgctctgtttccctgccagacaccacctttcccgtggacagagtggaacgcttggaattcacagctcatgttctttctcagaagtttgagaaagaactttccaaagtgagggaatatgtccaattaattagtttgtatgaaaagaaactgttaaacctaactgtccgaattgacatcatgggagaaggatacatttcttacactgaactggacttcgagctgataaggtagaagtgaaggagatggaaaaactggtcatacagctgaaggagagttttggtggaagctcagaaattgttgaccagctggaggtggagataagaaatatgactctcttggtagagaagcttgagacactagacaaaaacaatgtccttgccattcgccgagaaatcgtggctctgaagaccaagctgaaagagtgtgaggcctctaaagatcaaaacacccctgtcgtccaccctcctcccactccagggagctgtggtcatggtggtgtggtgaacatcagcaaaccgtctgtggttcagctcaactggagagggttttcttatctatatggtgcttggggtagggattactctccccagcatccaaacaaaggactgtattgggtggcgccattgaatacagatgggagactgttggagtattatatactgtacaacacactggatgatttgctattgtatataaatgctcgagagttgcggatcacctatggccaaggtagtggtacagcagtttacaacaacaacatgtacgtcaacatgtacaacaccgggaatattgccagagttaacctgaccaccaacacgattgctgtgactcaaactctccctaatgctgcctataataaccgcttttcatatgctaatgttgcttggcaagcatattgactttgctgtggatgagaatggattgtgggttatttattcaactgaagccagcactggttaacatggtgattagtaaactcaatgacaccacacttcaggtgctaaacacttggtataccaagcagtataaaccatctgcttctaacgccttcatggtatgtggggttctgtatgccacccgtactatgaacaccagaacagaagagattttttactattatgacacaaacacagggaaagagggcaaactagacattgtaatgcataagatgcaggaaaaagtgcagagcattaactataacccttttgaccagaaactttatgtctataacgatggttaccttctgaattatgatctttctgtcttgcagaagccccagtaagctgtttaggagttagggtgaaagagaaaatgtttgttgaaaaaatagtcttctccacttacttagatatctgcagatatctaagtaagtggagaagactattttttcaacaaacattttctctttcaccctaactcctaaacagcttactggggcttctgcaagacagaaagatcataattcagaaggtaaccatcgttatagacataaagtttctggtcaaaagggttatagttaatgctctgcactttttcctgcatcttatgcattacaatgtctagtttgccctctttccctgtgtttgtgtcataatagtaaaaaatctcttctgtttggcgtatagggattctttgtacaggaaatattgcccaatgactagtcctcatccatgtagcaccactaattcttccatgcctggaagaaacctggggacttagttaggtagattaatatctggagctcctcgagggaccaaatctccaacttttttttcccctcactagcacctggaatgatgctttgtatgtggcagataagtaaatttggcatgcttatatattctacatctgtaaagtgctgagttttatggagagaggcctttttatgcattaaattgtacatggcaaataaatcccagaaggatctgtagatgaggcacctgctttttcttttctctcattgtccaccttactaaaagtcagtagaatcttctacctcataacttccttccaaaggcagctcagaagattagaaccagacttactaaccaattccaccccccaccaacccccttctactgcctactttaaaaaaattaatagttttctatggaactgatctaagattagaaaaattaattttctttaatttcattatgaacttttatttacatgactctaagactataagaaaatctgatggcagtgacaaagtgctagcatttattgttatctaataaagaccttggagcatatgtgcaacttatgagtgtatcagttgttgcatgtaatttttgcctttgtttaagcctggaacttgtaagaaaatgaaaatttaatttttttttctaggacgagctatagaaaagctattgagagtatctagttaatcagtgcagtagttggaaaccttgctggtgtatgtgatgtgcttctgtgcttttgaatgactttatcatctagtctttgtctatttttcctttgatgttcaagtcctagtctataggattggcagtttaaatgctttactcccccttttaaaataaatgattaaaatgtgcttcgaaaaaaaaaaaaaaaaaaaaaaaaaaaaaaa

SEQ ID NO: 4479 - protein, 205 aa, Homo sapiens
MTERRVPFSLLRGPSWDPFRDWYPHSRLFDQAFGLPRLPEEWSQWLGGSSWPGYVRPLPPAAIESPAVAAPAYSRALSRQLSSGVSEIRHTADRWRVSLDVNHFAPDELTVKTKDGVVEITGKHEERQDEHGYISRCFTRKYTLPPGVDPTQVSSSLSPEGTLTVEAPMPKLATQSNEITIPVTFESRAQLGGPEAAKSDETAAK

SEQ ID NO: 4480 - DNA, 865 bp, Homo sapiens
ctcaaacaccgcctgctaaaaatacccgactggaggagcataaaagcgcagccgagcccagcgccccgcacttttctgagcagacgtccagagcagagtcagccagcatgaccgagcgccgcgtccccttctcgctcctgcggggccccagctgggaccccttccgcgactggtacccgcatagccgcctcttcgaccaggccttcgggctgccccggctgccggaggagtggtcgcagtggttaggcggcagcagctggccaggctacgtgcgccccctgccccccgccgccatcgagagccccgcagtggccgcgcccgcctacagccgcgcgctcagccggcaactcagcagcggggtctcggagatccggcacactgcggaccgctggcgcgtgtccctggatgtcaaccacttcgccccggacgagctgacggtcaagaccaaggatggcgtggtggagatcaccggcaagcacgaggagcggcaggacgagcatggctacatctcccggtgcttcacgcggaaatacacgctgccccccggtgtggaccccacccaagtttcctcctccctgtcccctgagggcacactgaccgtggaggcccccatgcccaagctagccacgcagtccaacgagatcaccatcccagtcaccttcgagtcgcgggcccagcttgggggcccagaagctgcaaaatccgatgagactgccgccaagtaaagccttagcctggatgcccacccctgctgccgccactggctgtgcctcccccgccacctgtgtgttcttttgatacatttatcttctgtttttctcaaataaagttcaaagcaaccacctgtaaaaaaaaaaaaaaaaaa

SEQ ID NO: 4481 - protein, 444 aa, Homo sapiens
MSSTSPNLQKAIDLASKAAQEDKAGNYEEALQLYQHAVQYFLHVVKYEAQGDKAKQSIRAKCTEYLDRAEKLKEYLKNKEKKAQKPVKEGQPSPADEKGNDSDGEGESDDPEKRKLQNQLQGAIVIDRPNVKWSDVAGLEGAKEALKEAVILPIKFPHLFTGKRTPWRGILLFGPPGTGKSYLAKAVATEANNSTFFSISSSDLVSKWLGESEKLVKNLFQLARENKPSIIFIDEIDSLCGSRSENESEAARRIKTEFLVQMQGVGVDNDGILVLGATNIPWVLDSAIRRRFEKRIYIPLPEPHARAAMFKLHLGTTQNSLTEADFRELGRKTDGYSGADIGIIVRDALMQPVRKVQSATHFKKVRGPSRADPNHLVDDLLTPCSPGDPGAIEMTWMDVPGDKLLEPVVSMSDMLRSLSNTKPTVNEHDLLKLKKFTEDFGQEG

SEQ ID NO: 4482 - DNA, 1978 bp, Homo sapiens
gggggagggtcggagctctggtggagagagtgttgtctaaaacaagttccggaagggaggctgcccttcgcggtccgagaaccaccggcctccccagtttgagggctgttaccccgtgcgcgcttcgacgttgctgctgttggctctcctcgcccctcgttcccttgggaaccgcctgggaactccgccatgtcatccacttcgcccaacctccagaaagcgatagatctggctagcaaagcagcgcaagaagacaaggctgggaactacgaagaagcccttcagctctatcagcatgctgtgcagtattttcttcatgtcgttaaatatgaagcacaaggtgataaagccaagcaaagtatcagggcaaagtgtacagaatatcttgatagagcagaaaaactaaaggagtacctgaaaaataaagagaaaaaagcacagaagccagtgaaagaaggacagccgagtccagcagatgagaaggggaatgacagtgatggggaaggagaatctgatgatcctgaaaaaaggaaactacagaatcaacttcaaggtgccattgttatagaccgaccaaatgtgaaatggagtgacgttgctggacttgaaggagccaaagaagcactgaaagaggctgtgatactgcctattaaatttcctcatctttttacaggcaagagaacaccttggaggggaatcctattatttgggccgcctggaacaggaaagtcctacttagccaaagctgtagcaacagaagccaacaactcaacatttttttcaatatcttcctctgatcttgtttctaagtggctaggtgaaagtgaaaaactggttaagaatttattccaacttgccagagagaacaagccctccattatcttcattgatgaaattgattctctctgtggttcaagaagtgaaaatgaaagtgaagccgcacgtagaattaagacggagttcctagtgcaaatgcaaggggttggtgtagacaatgatggaattttggttctgggagctacaaatataccctgggttctggattctgccattaggcgaagatttgagaaacgaatttatattcccttgccggaaccccatgcccgagcagcaatgtttaaactgcacctagggaccactcagaacagtctcacggaagcagactttcgggaacttgggaggaaaacagatggttattcaggggcagatataggtatcattgtacgtgatgcccttatgcagcctgttaggaaagtacagtcagctactcattttaaaaaggttcgcggaccttcccgagctgatcctaaccatcttgtagatgatctgctaacaccttgctctccaggtgaccctggtgccattgaaatgacgtggatggatgtccctggagataaacttttggagccagttgtttccatgtcggatatgttgcggtcactatctaacacaaaacctacagtcaatgaacatgacttgttgaaattaaagaagtttacagaagattttggtcaagaaggctaagccaaagacaaggaagatgcttaccatatgtattctttctttcatagatatttttgtctatttggatcgcattaattgtttccagtaaaactcttttaccacagggaaatacacatctcacttcagagttccattaggttttatattgtacttttcctccattacttattaaatactcctattaacaaaaggtacaaaataacaggttatgaggaaatgagcgatatatgaacggcataaaaacagaaattacccagtaaaaaggatgtcagaaattgacatacaaatatttacaatttttatgaatggtggtctttgcaaagagcatttatattttcttttttttttactaaaatgatatatgggtttattttatattttcaaaaaaattgttaaacatcattcttatcaatgtaaaatttacgaaaaaaaaaaaaaaaaaaaaaaaaaaaaa

SEQ ID NO: 4483 - protein, 125 aa, Homo sapiens
MHKEEHEVAVLGAPPSTILPRSTVINIHSETSVPDHVVWSLFNTLFLNWCCLGFIAFAYSVKSRDRKMVGDVTGAQAYASTAKCLNIWALILGILMTIGFILLLVFGSVTVYHIMLQIIQEKRGY

SEQ ID NO: 4484 - DNA, 647 bp, Homo sapiens
gctcactgagcaccgtcccagcatccggacaccacagcggcccttcgctccacgcagaaaaccacacttctcataccttcactcaacacttccttccccaaagccagaagatgcacaaggaggaacatgaggtggctgtgctgggggcaccccccagcaccatccttccaaggtccaccgtgattaacatccacagcgagacctccgtgcccgaccatgtcgtctggtccctgttcaacaccctcttcttgaactggtgctgtctgggcttcatagcattcgcctactccgtaaagtctagggacaggaagatggttggcgacgtgaccggggcccaggcctatgcctccaccgccaagtgcctgaacatctgggccctgattctgggcatcctcatgaccattggattcatcctgttactggtattcggctctgtaacagtctaccatattatgttacagataatacaggaaaaacggggttactagtagccgcccatagcctgcaacctttgcactccactgtgcaatgctggccctgcacgctggggctgttgcccctgcccccttggtcctgcccctagatacagcagtttatacccacacacctgtctacagtgtcattcaataaagtgcacgtgcttgtga

SEQ ID NO: 4485 - protein, 94 aa, Homo sapiens
MRTIAILAAILLVALQAQAESLQERADEATTQKQSGEDNQDLAISFAGNGLSALRTSGSQARATCYCRTGRCATRESLSGVCEISGRLYRLCCR

SEQ ID NO: 4486 - DNA, 449 bp, Homo sapiens
atatccactcctgctctccctcctgcaggtgaccccagccatgaggaccatcgccatccttgctgccattctcctggtggccctgcaggcccaggctgagtcactccaggaaagagctgatgaggctacaacccagaagcagtctggggaagacaaccaggaccttgctatctcctttgcaggaaatggactctctgctcttagaacctcaggttctcaggcaagagccacctgctattgccgaaccggccgttgtgctacccgtgagtccctctccggggtgtgtgaaatcagtggccgcctctacagactctgctgtcgctgagcttcctagatagaaaccaaagcagtgcaagattcagttcaaggtcctgaaaaaagaaaaacattttactctgtgtaccttgtgtctttctaaatttctctctccaaaataaagttcaagcatt

SEQ ID NO: 4487 - protein, 1211 aa, Homo sapiens
MPAPEQASLVEEGQPQTRQEAASTGPGMEPETTATTILASVKEQELQFQRLTRELEVERQIVASQLERCRLGAESPSIASTSSTEKSFPWRSTDVPNTGVSKPRVSDAVQPNNYLIRTEPEQGTLYSPEQTSLHESEGSLGNSRSSTQMNSYSDSGYQEAGSFHNSQNVSKADNRQQHSFIGSTNNHVVRNSRAEGQTLVQPSVANRAMRRVSSVPSRAQSPSYVISTGVSPSRGSLRTSLGSGFGSPSVTDPRPLNPSAYSSTTLPAARAASPYSQRPASPTAIRRIGSVTSRQTSNPNGPTPQYQTTARVGSPLTLTDAQTRVASPSQGQVGSSSPKRSGMTAVPQHLGPSLQRTVHDMEQFGQQQYDIYERMVPPRPDSLTGLRSSYASQHSQLGQDLRSAVSPDLHITPIYEGRTYYSPVYRSPNHGTVELQGSQTALYRTGVSGIGNLQRTSSQRSTLTYQRNNYALNTTATYAEPYRPIQYRVQECNYNRLQHAVPADDGTTRSPSIDSIQKDPREFAWRDPELPEVIHMLEHQFPSVQANAAAYLQHLCFGDNKVKMEVCRLGGIKHLVDLLDHRVLEVQKNACGALRNLVFGKSTDENKIAMKNVGGIPALLRLLRKSIDAEVRELVTGVLWNLSSCDAVKMTIIRDALSTLTNTVIVPHSGWNNSSFDDDHKIKFQTSLVLRNTTGCLRNLTSAGEEARKQMRSCEGLVDSLLYVIHTCVNTSDYDSKTVENCVCTLRNLSYRLELEVPQARLLGLNELDDLLGKESPSKDSEPSCWGKKKKKKKRTPQEDQWDGVGPIPGLSKSPKGVEMLWHPSVVKPYLTLLAESSNPATLEGSAGSLQNLSASNWKFAAYIRGGRPKRKGLPILVELLRMDNDRVVSSGATALRNMALDVRNKELIGKYAMRDLVNRLPGGNGPSVLSDETMAAICCALHEVTSKNMENAKALADSGGIEKLVNITKGRGDRSSLKVVKAAAQVLNTLWQYRDLRSIYKKDGWNQNHFITPVSTLERDRFKSHPSLSTTNQQMSPIIQSVGSTSSSPALLGIRDPRSEYDRTQPPMQYYNSQGDATHKGLYPGSSKPSPIYISSYSSPAREQNRRLQHQQLYYSQDDSNRKNFDAYRLYLQSPHSYEDPYFDDRVHFPASTDYSTQYGLKSTTNYVDFYSTKRPSYRAEQYPGSPDSWVYDQDAQQRNSFFLTLFRLR

SEQ ID NO: 4488 - DNA, 3871 bp, Homo sapiens
ctactgttgtttttgaggggcgggcagccgcgccgccgcggcacttttttaattttttcgggtgccgcagcagcgacccctcggcgccgatgtccctgatccctggagcgacgacggccgctgcctaagctgggaagaggaatgccagctcctgagcaggcctcattggtggaggaggggcaaccacagacccgccaggaagctgcctccactggcccaggcatggaacccgagaccacagccaccactattctagcatccgtgaaggagcaggagcttcagtttcagcgactcacccgagaactggaagtggaaaggcagattgttgccagtcagctagaaagatgtaggcttggagcagaatcaccaagcatcgccagcaccagctcaactgagaagtcatttccttggagatcaacagacgtgccaaatactggtgtaagcaaacctagagtttctgacgctgtccagcccaacaactatctcatcaggacagagccagaacaaggaaccctctattcaccagaacagacatctctccatgaaagtgagggatcattgggtaactcaagaagttcaacacaaatgaattcttattccgacagtggataccaggaagcagggagtttccacaacagccagaacgtgagcaaggcagacaacagacagcagcattcattcataggatcaactaacaaccatgtggtgaggaattcaagagctgaaggacaaacactggttcagccatcagtagccaatcgggccatgagaagagttagttcagttccatctagagcacagtctccttcttatgttatcagcacaggcgtgtctccttcaagggggtctctgagaacttctctgggtagtggatttggctctccgtcagtgaccgacccccgacctctgaaccccagtgcatattcctccaccacattacctgctgcacgggcagcctctccgtactcacagagacccgcctccccaacagctatacggcggattgggtcagtcacctcccggcagacctccaatcccaacggaccaacccctcaataccaaaccaccgccagagtggggtccccactgaccctgacggatgcacagactcgagtagcttccccatcccaaggccaggtggggtcgtcgtcccccaaacgctcagggatgaccgccgtaccacagcatctgggaccttcactgcaaaggactgttcatgacatggagcaattcggacagcagcagtatgacatttatgagaggatggttccacccaggccagacagcctgacaggcttacggagttcctatgctagtcagcatagtcagcttgggcaagaccttcgttctgccgtgtctcccgacttgcacattactcctatatatgaggggaggacctattacagcccagtgtaccgcagcccaaaccatggaactgtggagctccaaggatcgcagacggcgttgtatcgcacaggtgtatcaggtattggaaatctacaaaggacatccagccaacgaagtacccttacataccaaagaaataattatgctctgaacacaacagctacctacgcggagccctacaggcctatacaataccgagtgcaagagtgcaattataacaggcttcagcatgcagtgccggctgatgatggcaccacaagatccccatcaatagacagcattcagaaggaccccagggagtttgcctggcgtgatcctgagttgcctgaggtcattcacatgcttgagcaccagttcccatctgttcaggcaaatgcagcggcctacctgcagcacctgtgctttggtgacaacaaagtgaagatggaggtgtgtaggttagggggaatcaagcatctggttgaccttctggaccacagagttttggaagttcagaagaatgcttgtggtgcccttcgaaacctcgtttttggcaagtctacagatgaaaataaaatagcaatgaagaatgttggtgggatacctgccttgttgcgactgttgagaaaatctattgatgcagaagtaagggagcttgttacaggagttctttggaatttatcctcatgtgatgctgtaaaaatgacaatcattcgagatgctctctcaaccttaacaaacactgtgattgttccacattctggatggaataactcttcttttgatgatgatcataaaattaaatttcagacttcactagttctgcgtaacacgacaggttgcctaaggaacctcacgtccgcgggggaagaagctcggaagcaaatgcggtcctgcgaggggctggtagactcactgttgtatgtgatccacacgtgtgtgaacacatccgattacgacagcaagacggtggagaactgcgtgtgcaccctgaggaacctgtcctatcggctggagctggaggtgccccaggcccggttactgggactgaacgaattggatgacttactaggaaaagagtctcccagcaaagactctgagccaagttgctgggggaagaagaagaaaaagaaaaagaggactccgcaagaagatcaatgggatggagttggtcctatcccaggactgtcgaagtcccccaaaggggttgagatgctgtggcacccatcggtggtaaaaccatatctgactcttctagcagaaagttccaacccagccaccttggaaggctctgcagggtctctccagaacctctctgctagcaactggaagtttgcagcatatatccggggcggccgtccgaaaagaaaagggctccccatccttgtggagcttctgagaatggataacgatagagttgtttcttccggtgcaacagccttgaggaatatggcactagatgttcgcaacaaggagctcataggcaaatacgccatgcgagacctggtcaaccggctccccggcggcaatggccccagtgtcttgtctgatgagaccatggcagccatctgctgtgctctgcacgaggtcaccagcaaaaacatggagaacgcaaaagccctggccgactcaggaggcatagagaagctggtgaacataaccaaaggcaggggcgacagatcatctctgaaagtggtgaaggcagcagcccaggtcttgaatacattatggcaatatcgggacctccggagcatttataaaaaggatgggtggaatcagaaccattttattacacctgtgtcgacattggagcgagaccgattcaaatcacatccttccttgtctaccaccaaccaacagatgtcacccatcattcagtcagtcggcagcacctcttcctcaccagcactgttaggaatcagagaccctcgctctgaatacgataggacccagccacctatgcagtattacaatagccaaggggatgccacacataaaggcctgtaccctggctccagcaaaccttcaccaatttacatcagttcctattcctcaccagcaagagaacaaaatagacggctacagcatcaacagctgtattatagtcaagatgactccaacagaaagaactttgatgcatacagattgtatttgcagtctcctcatagctatgaagatccttattttgatgaccgagttcactttccagcttctactgattactcaacacagtatggactgaaatcgaccacaaattatgtagacttttattccactaaacgaccttcttatagagcagaacagtacccagggtccccagactcatgggtgtacgatcaagatgcccaacagaggaactctttctttctaaccttgttcagattgaggtgaaaagtccatcttgctgatttcatgattgaaatgtgaaagtgaagtggaaggaatgaatgaagtgtgtttttttttcctttttgaggaattatca

SEQ ID NO: 4489 - protein, 158 aa, Homo sapiens [sequence omitted]

SEQ ID NO: 4490 - DNA, 1856 bp, Homo sapiens
ggatgggaagcgagcatggtgagtcctcaagtcgcagctgggcctgccacgtgggagtggagggtggaggaacgtgtggagtttcggagtccagcccagtgcgagacagccttgaaaccgtggttggcgggcgctccactccgctctgggctcgaaccctgcctgaccctagctgtgccccccactttctccctgtctggcccctgctccccgccccctcacttagaggagggcacggggaagggcaaacggtccagagggcgggcggctgcgggctcctctgcatcatgtgaggagggcgtggggaaggacatcctggtggggcccgatctgggctgcctccagcccgggcctgtgtcttggacttagtcgtggacctggaggccagtgcccggctggccctgtcaccctctcgctgtgacgccagcgcctgctgactggaggacccaggttccttcgcctgctttttctcaggctgccctgaggatctgtgtttggtgaaaaggagccaaattcacctgcagggcaggcggctctagcagcttcagaagcctggtgccctggcgacactggacctgccttggcttctttgatcccaaccccacccccgatttctgctctgctgactggggaagtcatcgtgccacccagaacctgagtgcgggcctctcagagctccttcgtccgtgggtctgccggggactgggccttgtctccctggcgagtgccaggtgaggctgcggcggctccgacgcaggtggagctgctgacctggcccctttctgcggctgcgagggactttgaacatgtcggggatcgccctcagcagactcgcccaggagaggaaagcatggaggaaagaccacccatttggtttcgtggctgtcccaacaaaaaatcccgatggcacgatgaacctcatgaactgggagtgcgccattccaggaaagaaagggactccgtgggaaggaggcttgtttaaactacggatgcttttcaaagatgattatccatcttcgccaccaaaatgtaaattcgaaccaccattatttcacccgaatgtgtacccttcggggacagtgtgcctgtccatcttagaggaggacaaggactggaggccagccatcacaatcaaacagatcctattaggaatacaggaacttctaaatgaaccaaatatccaagacccagctcaagcagaggcctacacgatttactgccaaaacagagtggagtacgagaaaagggtccgagcacaagccaagaagtttgcgccctcataagcagcgaccttgtggcatcgtcagaaggaagggattggtttggcaagaacttgtttacaacatttttgcaaatctaaagttgctccatacaatgactagtcacctgggggggttgggcgggcgccatcttccattgccgccgcgggtgtgcggtctcgattcgctgaattgcccgtttccatacagggtctcttccttcggtcttttgtatttttgattgttatgtaaaactcgcttttattttaatattgatgtcagtatttcaactgctgtaaaattataaacttttatacttgggtaagtcccccaggcgagttcctcgctctgggatgcaggcatgcttctcaccgtgcagagctgcacttggcctcagctggctgtatggaaatgcaccctccctcctgcgctcctctctagaacctgggctgtgctgcttttgagcctcagaccccagggcagcatctcggttctgcgccacttcctttgtgtttatatggcgttttgtctgtgttgctgtttaggtaaataaactgtttatataaaaaaaaaaaaaaaaaaaaaaaaaaaaaaaaa

SEQ ID NO: 4491 - protein, 89 aa, Homo sapiens
MCDRKAVIKNADMSEEMQQDSVECATQALEKYNIEKDIAAHIKKEFDKKYNPTWHCIVGRNFGSYVTHETKHFIYFYLGQVAILLFKSG

SEQ ID NO: 4492 - DNA, 643 bp, Homo sapiens
ggtagcgacggtagctctagccgggcctgagctgtgctagcacctcccccaggagaccgttgcagtcggccagcccccttctccacggtaaccatgtgcgaccgaaaggccgtgatcaaaaatgcggacatgtcggaagagatgcaacaggactcggtggagtgcgctactcaggcgctggagaaatacaacatagagaaggacattgcggctcatatcaagaaggaatttgacaagaagtacaatcccacctggcattgcatcgtggggaggaacttcggtagttatgtgacacatgaaaccaaacacttcatctacttctacctgggccaagtggccattcttctgttcaaatctggttaaaagcatggactgtgccacacacccagtgatccatccagaaacaaggactgcagcctaaattccaaataccagagactgaaattttcagccttgctaagggaacatctcgatgtttgaacctttgttgtgttttgtacagggcattctctgtactagtttgtcgtggttataaaacaattagcagaatagcctacatttgtatttattttctattccatacttctgcccacgttgttttctctcaaaatccattcctttaaaaaataaatctgatgcaccg

SEQ ID NO: 4493 - protein, 298 aa, Homo sapiens
MENFQKVEKIGEGTYGVVYKARNKLTGEVVALKKIRLDTETEGVPSTAIREISLLKELNHPNIVKLLDVIHTENKLYLVFEFLHQDLKKFMDASALTGIPLPLIKSYLFQLLQGLAFCHSHRVLHRDLKPQNLLINTEGAIKLADFGLARAFGVPVRTYTHEVVTLWYRAPEILLGCKYYSTAVDIWSLGCIFAEMVTRRALFPGDSEIDQLFRIFRTLGTPDEVVWPGVTSMPDYKPSFPKWARQDFSKVVPPLDEDGRSLLSQMLHYDPNKRISAKAALAHPFFQDVTKPVPHLRL

SEQ ID NO: 4494 - DNA, 1297 bp, Homo sapiens
  misc_feature 51, 278, 279: n = A,T,C or G
cgttggccaaattgacaagagcgagaggtatactgcgttccatcccgaccnggggccacggtactgggccctgtttccccctcctcggcccccgagagccagggtccgccttctgcagggttcccaggcccccgctccagggccgggctgacccgactcgctggcgcttcatggagaacttccaaaaggtggaaaagatcggagagggcacgtacggagttgtgtacaaagccagaaacaagttgacgggagaggtggtggcgcttaagaaaatccgnntggacactgagactgagggtgtgcccagtactgccatccgagagatctctctgcttaaggagcttaaccatcctaatattgtcaagctgctggatgtcattcacacagaaaataaactctacctggtttttgaatttctgcaccaagatctcaagaaattcatggatgcctctgctctcactggcattcctcttcccctcatcaagagctatctgttccagctgctccagggcctagctttctgccattctcatcgggtcctccaccgagaccttaaacctcagaatctgcttattaacacagagggggccatcaagctagcagactttggactagccagagcttttggagtccctgttcgtacttacacccatgaggtggtgaccctgtggtaccgagctcctgaaatcctcctgggctgcaaatattattccacagctgtggacatctggagcctgggctgcatctttgctgagatggtgactcgccgggccctattccctggagattctgagattgaccagctcttccggatctttcggactctggggaccccagatgaggtggtgtggccaggagttacttctatgcctgattacaagccaagtttccccaagtgggcccggcaagattttagtaaagttgtacctcccctggatgaagatggacggagcttgttatcgcaaatgctgcactacgaccctaacaagcggatttcggccaaggcagccctggctcaccctttcttccaggatgtgaccaagccagtaccccatcttcgactctgatagccttcttgaagcccccagccctaatctcaccctctcctccagtgtgggcttgaccaggcttggccttgggctatttggactcaggtgggccctctgaacttgccttaaacactcaccttctagtcttggccagccaactctgggaatacaggggtgaaaggggggaaccagtgaaaatgaaaggaagtttcagtattagattgcacttaagttagcctccaccaccc
